United States Patent Application Publication US 2007/0214517 A1 - sequence listing, part 86

SEQ ID NO: 111999 - protein, 116 aa, Zea mays subsp. mays
  misc_feature (1)..(116): Ceres Seq. ID no. 13599502
  misc_feature (1)..(56): Pfam Name: Heavy-metal-associated domain Pfam Description: Heavy-metal-associated domain
  misc_feature (1)..(116): Homolog of NCBI NO: 23304411 NR Description: farnesylated protein 1 [Hordeum vulgare subsp.
  misc_feature (1)..(116): Homolog of NCBI NO: 38346843 NR Description: OSJNBa0091C12.3 [Oryza sativa (japonica
  misc_feature (1)..(116): Homolog of NCBI NO: 15235984 NR Description: copper chaperone (CCH)-related [Arabidopsis
  misc_feature (1)..(116): Homolog of NCBI NO: 34914538 NR Description: OSJNBa0094H06.16 [Oryza sativa (japonica
  misc_feature (1)..(116): Homolog of NCBI NO: 28866017 NR Description: farnesylated protein 2 [Hordeum vulgare subsp.
  misc_feature (1)..(116): Homolog of NCBI NO: 28866019 NR Description: farnesylated protein 3 [Hordeum vulgare subsp.
  misc_feature (1)..(116): Homolog of NCBI NO: 15219990 NR Description: copper chaperone (CCH)-related [Arabidopsis
  misc_feature (1)..(116): Homolog of NCBI NO: 32442810 NR Description: putative farnesylated protein [Brassica rapa
  misc_feature (1)..(116): Homolog of NCBI NO: 15223925 NR Description: copper chaperone (CCH)-related [Arabidopsis
  misc_feature (1)..(116): Homolog of NCBI NO: 15237967 NR Description: copper chaperone (CCH)-related [Arabidopsis
MDCDGCERKLRNVVRRMKGVKTVEVNRKQSRLTVNGHVDPNKVLKRVKSTGKKAEFWPYIPQHMVYYPFAPGMYDKRAPAGHIRNPTQAFPAANAPGENYVSLFSDDNVHAACSIM

SEQ ID NO: 112000 - protein, 100 aa, Zea mays subsp. mays
  misc_feature (1)..(100): Ceres Seq. ID no. 13599503
  misc_feature (1)..(100): Homolog of NCBI NO: 23304411 NR Description: farnesylated protein 1 [Hordeum vulgare subsp.
  misc_feature (1)..(100): Homolog of NCBI NO: 38346843 NR Description: OSJNBa0091C12.3 [Oryza sativa (japonica
  misc_feature (1)..(100): Homolog of NCBI NO: 15235984 NR Description: copper chaperone (CCH)-related [Arabidopsis
  misc_feature (1)..(100): Homolog of NCBI NO: 34914538 NR Description: OSJNBa0094H06.16 [Oryza sativa (japonica
  misc_feature (1)..(100): Homolog of NCBI NO: 28866017 NR Description: farnesylated protein 2 [Hordeum vulgare subsp.
  misc_feature (1)..(100): Homolog of NCBI NO: 28866019 NR Description: farnesylated protein 3 [Hordeum vulgare subsp.
  misc_feature (1)..(100): Homolog of NCBI NO: 15219990 NR Description: copper chaperone (CCH)-related [Arabidopsis
  misc_feature (1)..(100): Homolog of NCBI NO: 32442810 NR Description: putative farnesylated protein [Brassica rapa
  misc_feature (1)..(100): Homolog of NCBI NO: 15223925 NR Description: copper chaperone (CCH)-related [Arabidopsis
  misc_feature (1)..(100): Homolog of NCBI NO: 15237967 NR Description: copper chaperone (CCH)-related [Arabidopsis
MKGVKTVEVNRKQSRLTVNGHVDPNKVLKRVKSTGKKAEFWPYIPQHMVYYPFAPGMYDKRAPAGHIRNPTQAFPAANAPGENYVSLFSDDNVHAACSIM

SEQ ID NO: 112001 - DNA, 1409 bp, Zea mays subsp. mays
  misc_feature (1)..(1409): Ceres Seq. ID no. 15226685
ataggtatagccaaccgtccaacccattgctactccacaccgatgcgatgctcccatcgccgccggcgacctcgccggcgcggctgcacaagctggtgacctcgcagcaggacccgctcctcgcgctggagctcgtcaacgtcacctccccgactaccacgccgcaccctgccacgctccactctctcctgctccgcctcgcccgccgccgcgaccacctaccccacgcgctcgcgctcctccgccgcctcccgtccccgccgtccccgcgcctccttctcccgcttctcctcgcggcgctccgtctccgccggccgcctcagctctttctctccaccttcaactccctcttcgtctcggggccaagccccctgccgctccacccccatctcctcctccgcctcctcggcgttctatcctccaccccatcccacttcccgtccgcgcttcacctccttcgcctcgtctcttcgcggctacctctccccgctccgctcgtcctcgcctcccacaacctgctaatcgacgccgcggcacgatccggccacgtcgccgtgtcactctcgctcttccaccgcctccgctcactccatgtatcccccgacgccgacacctaccgcattcttacccaatcactctgccgcaaggcccaggtccgcaccgcggctacactgctcgacgaaatgctgcacaggggcatccctgccgatccgctggcgtacaccaccgtgctgaacgctctctgccgcaagaagcagctccgagaggcataccgcctgctctgtctcatgcgaggccgtggagtctcccctgacattgtgcattacaacacggtcatcgttggcatgtgccgcgagggccggccactggatgcctgcaaggttgttgttgatatgatggacaatggatgtacaccgaatgcagtgacatatggcacagtggtgaatgggctgtgcgtaagcggattatacgataaggcggaggcctacctggtggacatggttggtaaagggcttgtgccacatttctcggtgtttcattcagttatcaggggttgctgtacagttgggaaagtagaagaggctgcacaaattatgagtcggatgcttgatcttggagtggttccgcatgttgagagctggagttcagtgatcaggtgcgtttgtaaggatgaggattgtattgaggcagaattgttgcagattgtgggaaggcagcgtggttcaaacatgatctctgacagagtaccttaagtgatttcacttgacatatgcaaaacaaactattgagctttaatctctgttggatgtaaaggaacaattctgcaagaagatagcagtagatgtggcaaaaactggacagcatgaacaattttcttgctgaagtgcctctagtggagtattaggagc

SEQ ID NO: 112002 - protein, 416 aa, Zea mays subsp. mays
  misc_feature (1)..(416): Ceres Seq. ID no. 15226686
  misc_feature (273)..(307): Pfam Name: PPR repeat Pfam Description: PPR repeat
  misc_feature (167)..(395): Homolog of NCBI NO: 15218325 NR Description: pentatricopeptide (PPR) repeat-containing protein
  misc_feature (169)..(399): Homolog of NCBI NO: 38567720 NR Description: B1358B12.18 [Oryza sativa (japonica
  misc_feature (18)..(334): Homolog of NCBI NO: 15234170 NR Description: pentatricopeptide (PPR) repeat-containing protein
  misc_feature (169)..(389): Homolog of NCBI NO: 34910106 NR Description: B1100D10.28 [Oryza sativa (japonica
  misc_feature (21)..(407): Homolog of NCBI NO: 34911020 NR Description: OJ1125_C04.15 [Oryza sativa (japonica
  misc_feature (164)..(416): Homolog of NCBI NO: 15237375 NR Description: pentatricopeptide (PPR) repeat-containing protein
  misc_feature (167)..(392): Homolog of NCBI NO: 38567720 NR Description: B1358B12.18 [Oryza sativa (japonica
  misc_feature (172)..(400): Homolog of NCBI NO: 38567720 NR Description: B1358B12.18 [Oryza sativa (japonica
  misc_feature (169)..(404): Homolog of NCBI NO: 15218325 NR Description: pentatricopeptide (PPR) repeat-containing protein
  misc_feature (18)..(398): Homolog of NCBI NO: 7486352 NR Description: hypothetical protein F3D13.1 - Arabidopsis
RYSQPSNPLLLHTDAMLPSPPATSPARLHKLVTSQQDPLLALELVNVTSPTTTPHPATLHSLLLRLARRRDHLPHALALLRRLPSPPSPRLLLPLLLAALRLRRPPQLFLSTFNSLFVSGPSPLPLHPHLLLRLLGVLSSTPSHFPSALHLLRLVSSRLPLPAPLVLASHNLLIDAAARSGHVAVSLSLFHRLRSLHVSPDADTYRILTQSLCRKAQVRTAATLLDEMLHRGIPADPLAYTTVLNALCRKKQLREAYRLLCLMRGRGVSPDIVHYNTVIVGMCREGRPLDACKVVVDMMDNGCTPNAVTYGTVVNGLCVSGLYDKAEAYLVDMVGKGLVPHFSVFHSVIRGCCTVGKVEEAAQIMSRMLDLGVVPHVESWSSVIRCVCKDEDCIEAELLQIVGRQRGSNMISDRVP

SEQ ID NO: 112003 - protein, 401 aa, Zea mays subsp. mays
  misc_feature (1)..(401): Ceres Seq. ID no. 15226687
  misc_feature (258)..(292): Pfam Name: PPR repeat Pfam Description: PPR repeat
  misc_feature (152)..(380): Homolog of NCBI NO: 15218325 NR Description: pentatricopeptide (PPR) repeat-containing protein
  misc_feature (154)..(384): Homolog of NCBI NO: 38567720 NR Description: B1358B12.18 [Oryza sativa (japonica
  misc_feature (3)..(319): Homolog of NCBI NO: 15234170 NR Description: pentatricopeptide (PPR) repeat-containing protein
  misc_feature (154)..(374): Homolog of NCBI NO: 34910106 NR Description: B1100D10.28 [Oryza sativa (japonica
  misc_feature (6)..(392): Homolog of NCBI NO: 34911020 NR Description: OJ1125_C04.15 [Oryza sativa (japonica
  misc_feature (149)..(401): Homolog of NCBI NO: 15237375 NR Description: pentatricopeptide (PPR) repeat-containing protein
  misc_feature (152)..(377): Homolog of NCBI NO: 38567720 NR Description: B1358B12.18 [Oryza sativa (japonica
  misc_feature (157)..(385): Homolog of NCBI NO: 38567720 NR Description: B1358B12.18 [Oryza sativa (japonica
  misc_feature (154)..(389): Homolog of NCBI NO: 15218325 NR Description: pentatricopeptide (PPR) repeat-containing protein
  misc_feature (3)..(383): Homolog of NCBI NO: 7486352 NR Description: hypothetical protein F3D13.1 - Arabidopsis
MLPSPPATSPARLHKLVTSQQDPLLALELVNVTSPTTTPHPATLHSLLLRLARRRDHLPHALALLRRLPSPPSPRLLLPLLLAALRLRRPPQLFLSTFNSLFVSGPSPLPLHPHLLLRLLGVLSSTPSHFPSALHLLRLVSSRLPLPAPLVLASHNLLIDAAARSGHVAVSLSLFHRLRSLHVSPDADTYRILTQSLCRKAQVRTAATLLDEMLHRGIPADPLAYTTVLNALCRKKQLREAYRLLCLMRGRGVSPDIVHYNTVIVGMCREGRPLDACKVVVDMMDNGCTPNAVTYGTVVNGLCVSGLYDKAEAYLVDMVGKGLVPHFSVFHSVIRGCCTVGKVEEAAQIMSRMLDLGVVPHVESWSSVIRCVCKDEDCIEAELLQIVGRQRGSNMISDRVP

SEQ ID NO: 112004 - DNA, 718 bp, Zea mays subsp. mays
  misc_feature (1)..(718): Ceres Seq. ID no. 12635807
ataacccacagagaacccaagaaaccttctcaaatcctctaaagaaaagaaatggcctccacagctatctcaagcgtcatcgtcggaacatccttcctccgccgtcaaacatctcccatcagcctccgttccctccccttagccaacactcagaccctcttcggcctcaagtcaggaaccgcacgtggtggacgcgtcacagccatggctacatacaaggtcaagttcatcactcccgaaggagagcaagaggttgagtgcgacgacgacgtttacgtcctcgacgctgctgaggaagccgggatcgacttgccttactcttgccgtgccggttcttgctcgagctgtgcaggtaaagttgtgtctggttttgttgaccagtctgaccagagtttcctcgatgatgaccagattgctgcagggtttgttctcacctgtgcggcttatcctacttctgatgttaccattgagacccacagagaagatgacattgtttaagacaaaagctccattaacatgctgcttttgatggtttcataatcattcatgtctttacattttgggttgagtttgttgttactttagtataatctatattgttgtctgttgtaattgttcttggtttggaccatcttttggttagatcaatggataactgtttcaaacttatggtaatgcaatttctgaagaacttttgatgagaaaaaaaaaaaaaaaa

SEQ ID NO: 112005 - protein, 148 aa, Zea mays subsp. mays; identical to SEQ ID NO: 60989
  misc_feature (1)..(148): Ceres Seq. ID no. 12635808
  misc_feature (60)..(135): Pfam Name: 2Fe-2S iron-sulfur cluster binding domain Pfam Description: 2Fe-2S iron-sulfur cluster binding domain
  misc_feature (1)..(147): Homolog of NCBI NO: 119931 NR Description: Ferredoxin I, chloroplast precursor
  misc_feature (53)..(147): Homolog of NCBI NO: 364015 NR Description: ferredoxin LFdA
  misc_feature (1)..(147): Homolog of NCBI NO: 3023743 NR Description: Ferredoxin I, chloroplast precursor
  misc_feature (53)..(148): Homolog of NCBI NO: 119980 NR Description: FERREDOXIN
  misc_feature (53)..(148): Homolog of NCBI NO: 119959 NR Description: FERREDOXIN, LEAF L-A
  misc_feature (53)..(148): Homolog of NCBI NO: 947124 NR Description: ferredoxin component a1
  misc_feature (53)..(148): Homolog of NCBI NO: 81707 NR Description: ferredoxin [2Fe-2S] A, leaf - radish
  misc_feature (1)..(118): Homolog of NCBI NO: 16604416 NR Description: At1g10960/T19D16_12 [Arabidopsis thaliana]
  misc_feature (1)..(148): Homolog of NCBI NO: 15220256 NR Description: ferredoxin precusor isolog
  misc_feature (1)..(148): Homolog of NCBI NO: 15219837 NR Description: ferrodoxin precursor

SEQ ID NO: 112006 - protein, 97 aa, Zea mays subsp. mays; identical to SEQ ID NO: 60990
  misc_feature (1)..(97): Ceres Seq. ID no. 12635809
  misc_feature (9)..(84): Pfam Name: 2Fe-2S iron-sulfur cluster binding domain Pfam Description: 2Fe-2S iron-sulfur cluster binding domain
  misc_feature (1)..(96): Homolog of NCBI NO: 119931 NR Description: Ferredoxin I, chloroplast precursor
  misc_feature (2)..(96): Homolog of NCBI NO: 364015 NR Description: ferredoxin LFdA
  misc_feature (1)..(96): Homolog of NCBI NO: 3023743 NR Description: Ferredoxin I, chloroplast precursor
  misc_feature (2)..(97): Homolog of NCBI NO: 119980 NR Description: FERREDOXIN
  misc_feature (2)..(97): Homolog of NCBI NO: 119959 NR Description: FERREDOXIN, LEAF L-A
  misc_feature (2)..(97): Homolog of NCBI NO: 947124 NR Description: ferredoxin component a1
  misc_feature (2)..(97): Homolog of NCBI NO: 81707 NR Description: ferredoxin [2Fe-2S] A, leaf - radish
  misc_feature (1)..(67): Homolog of NCBI NO: 16604416 NR Description: At1g10960/T19D16_12 [Arabidopsis thaliana]
  misc_feature (1)..(97): Homolog of NCBI NO: 15220256 NR Description: ferredoxin precusor isolog
  misc_feature (1)..(97): Homolog of NCBI NO: 15219837 NR Description: ferrodoxin precursor

SEQ ID NO: 112007 - protein, 84 aa, Zea mays subsp. mays; identical to SEQ ID NO: 60991
  misc_feature (1)..(84): Ceres Seq. ID no. 12635810

SEQ ID NO: 112008 - DNA, 877 bp, Zea mays subsp. mays
  misc_feature (1)..(877): Ceres Seq. ID no. 12635132
aataccaacggtttcattcatatctgactcagtgttcctgattctccagcgaccaagacaagactatcttcgcagtccaggagatgttaggaagctccttagcttcccctttggctacattgggtcctgccaattgctttcgacactctgcaggtgattctctaacatgcactagtgttctaccattgagcctgaacttgtcatatcatggtgtggctggaggagtaaggacatctcgtggtccacgaaacaagtggatagtggtctgttcaccaacgcaagtggaaacctctggtgatgagccaaagacatgggaagaatgcaaagaagctctgtctcgttttgatttcagcgtagaggagcaagacaagatactaggaaaagcgtttggtcatatccactcgccctactggacagaagaacgagtgaaagagaatccaaaggtggaagctttgaatcacgtacttgagttccttagaagtctcggtttgtcagacgaggatcttcacaaagtgctgaagaagttcccggaagtactcggttgcagcttagaagaagagatgaaacccaacattgggatcttggaaaatcaatgggggattacgggtaagtcgctgcgaagtctgttgctccggaacccgaaagtgttggggtacaatgtggattgtaaaggagattgtattgctcagtgcactcggtgttgggttcggttttagtctttctttccctagttcgtttgtttgtctctagtctctccatcttatggtttcattacagctactgaaataaactagcctcgatggttgaaggaccaatgtgaatgcttgtactttagatgaatcacacattaatttttatttgatgaattagaatgttt

SEQ ID NO: 112009 - protein, 210 aa, Zea mays subsp. mays
  misc_feature (1)..(210): Ceres Seq. ID no. 12635133
  misc_feature (128)..(194): Pfam Name: mTERF Pfam Description: mTERF
  misc_feature (46)..(210): Homolog of NCBI NO: 28376711 NR Description: unknown protein [Oryza sativa (japonica
  misc_feature (1)..(210): Homolog of NCBI NO: 15810253 NR Description: unknown protein [Arabidopsis thaliana]
  misc_feature (1)..(210): Homolog of NCBI NO: 25372638 NR Description: hypothetical protein AT4g09620 [imported] -
  misc_feature (1)..(210): Homolog of NCBI NO: 30681137 NR Description: expressed protein [Arabidopsis thaliana]
MLGSSLASPLATLGPANCFRHSAGDSLTCTSVLPLSLNLSYHGVAGGVRTSRGPRNKWIVVCSPTQVETSGDEPKTWEECKEALSRFDFSVEEQDKILGKAFGHIHSPYWTEERVKENPKVEALNHVLEFLRSLGLSDEDLHKVLKKFPEVLGCSLEEEMKPNIGILENQWGITGKSLRSLLLRNPKVLGYNVDCKGDCIAQCTRCWVRF

SEQ ID NO: 112010 - DNA, 715 bp, Zea mays subsp. mays
  misc_feature (1)..(715): Ceres Seq. ID no. 13599518
actcacactcagattcaaatcagaaaacttgagatcaatcggagaagtaagaagaagatgggagctttcgggaagctgatcgacgcgatcctcttcttatacttcgctctgatggtgttcatcgcgccgctcttcgacgcccaaacggtgcttcctaaagaaatctacccggcgattctcaccgatctgaaccgcaactacatcgccgactttggagattacttgctcgcggaggagccgcatttcctcgtcggactcatctggcacgagctcgtactcctgtggccgctctcgatcgccaacgtctacgcgattctcgccggaaagtcgtggttcgccaccacgtgcttgctctacggagcttccgtcgtcacttccatgtctgctgtcctgggagagatgctaggttcggggaaggcatctcagaaattgctaatgatgtatgtgcctttcatgggtattgggatactggctactcttcgtggtttagtctctcgttcaaccaagagcactggatctgtcgacaagagatccgctgttaagcctaggaggaagctggcctagaagaggtggtttctcgtttgtgatagttggttctaatttatccttttctttctttatgtacctttggttgaaagcgtttcctctgaactctcttgtttgttctcagcaacaatgaaatgtttccttgatcgaaatcaaattcattgctttt

SEQ ID NO: 112011 - protein, 187 aa, Zea mays subsp. mays
  misc_feature (1)..(187): Ceres Seq. ID no. 15218847
  misc_feature (20)..(135): Homolog of NCBI NO: 27688749 NR Description: similar to RIKEN cDNA 1810014L12
  misc_feature (20)..(135): Homolog of NCBI NO: 19526880 NR Description: RIKEN cDNA 1810014L12 [Mus musculus]
  misc_feature (21)..(135): Homolog of NCBI NO: 2135212 NR Description: gene MAC30 protein - human (fragment)
  misc_feature (20)..(183): Homolog of NCBI NO: 28411944 NR Description: OSJNBa0027N13.37 [Oryza sativa (japonica
  misc_feature (20)..(183): Homolog of NCBI NO: 28411943 NR Description: OSJNBa0027N13.35 [Oryza sativa (japonica
  misc_feature (20)..(187): Homolog of NCBI NO: 15220447 NR Description: hypothetical protein [Arabidopsis thaliana]
  misc_feature (20)..(187): Homolog of NCBI NO: 18402955 NR Description: expressed protein [Arabidopsis thaliana]
  misc_feature (20)..(187): Homolog of NCBI NO: 18390494 NR Description: expressed protein [Arabidopsis thaliana]
THTQIQIRKLEINRRSKKKMGAFGKLIDAILFLYFALMVFIAPLFDAQTVLPKEIYPAILTDLNRNYIADFGDYLLAEEPHFLVGLIWHELVLLWPLSIANVYAILAGKSWFATTCLLYGASVVTSMSAVLGEMLGSGKASQKLLMMYVPFMGIGILATLRGLVSRSTKSTGSVDKRSAVKPRRKLA

SEQ ID NO: 112012 - protein, 168 aa, Zea mays subsp. mays
  misc_feature (1)..(168): Ceres Seq. ID no. 15218848
  misc_feature (1)..(116): Homolog of NCBI NO: 27688749 NR Description: similar to RIKEN cDNA 1810014L12
  misc_feature (1)..(116): Homolog of NCBI NO: 19526880 NR Description: RIKEN cDNA 1810014L12 [Mus musculus]
  misc_feature (2)..(116): Homolog of NCBI NO: 2135212 NR Description: gene MAC30 protein - human (fragment)
  misc_feature (1)..(164): Homolog of NCBI NO: 28411944 NR Description: OSJNBa0027N13.37 [Oryza sativa (japonica
  misc_feature (1)..(164): Homolog of NCBI NO: 28411943 NR Description: OSJNBa0027N13.35 [Oryza sativa (japonica
  misc_feature (1)..(168): Homolog of NCBI NO: 15220447 NR Description: hypothetical protein [Arabidopsis thaliana]
  misc_feature (1)..(168): Homolog of NCBI NO: 18402955 NR Description: expressed protein [Arabidopsis thaliana]
  misc_feature (1)..(168): Homolog of NCBI NO: 18390494 NR Description: expressed protein [Arabidopsis thaliana]
MGAFGKLIDAILFLYFALMVFIAPLFDAQTVLPKEIYPAILTDLNRNYIADFGDYLLAEEPHFLVGLIWHELVLLWPLSIANVYAILAGKSWFATTCLLYGASVVTSMSAVLGEMLGSGKASQKLLMMYVPFMGIGILATLRGLVSRSTKSTGSVDKRSAVKPRRKLA

SEQ ID NO: 112013 - protein, 150 aa, Zea mays subsp. mays
  misc_feature (1)..(150): Ceres Seq. ID no. 15218849
  misc_feature (1)..(98): Homolog of NCBI NO: 27688749 NR Description: similar to RIKEN cDNA 1810014L12
  misc_feature (1)..(98): Homolog of NCBI NO: 19526880 NR Description: RIKEN cDNA 1810014L12 [Mus musculus]
  misc_feature (1)..(98): Homolog of NCBI NO: 2135212 NR Description: gene MAC30 protein - human (fragment)
  misc_feature (1)..(146): Homolog of NCBI NO: 28411944 NR Description: OSJNBa0027N13.37 [Oryza sativa (japonica
  misc_feature (1)..(146): Homolog of NCBI NO: 28411943 NR Description: OSJNBa0027N13.35 [Oryza sativa (japonica
  misc_feature (1)..(150): Homolog of NCBI NO: 15220447 NR Description: hypothetical protein [Arabidopsis thaliana]
  misc_feature (1)..(150): Homolog of NCBI NO: 18402955 NR Description: expressed protein [Arabidopsis thaliana]
  misc_feature (1)..(150): Homolog of NCBI NO: 18390494 NR Description: expressed protein [Arabidopsis thaliana]
MVFIAPLFDAQTVLPKEIYPAILTDLNRNYIADFGDYLLAEEPHFLVGLIWHELVLLWPLSIANVYAILAGKSWFATTCLLYGASVVTSMSAVLGEMLGSGKASQKLLMMYVPFMGIGILATLRGLVSRSTKSTGSVDKRSAVKPRRKLA

SEQ ID NO: 112014 - DNA, 1625 bp, Zea mays subsp. mays
  misc_feature (1)..(1625): Ceres Seq. ID no. 15227139
gcagatggccaacgcaattcaccagtagtagtagttgtagcggcataactagctatggctaccaccatggcggctaacgacccgacgagcatccgcgtggttagccgccggctggtgaaggcctccgacgcttccatccagcctcatgtcatgtccctctccaacctcgacctctacgtctgcgactcacagctcggcacgctgtgcgtctaccccaacgccggcggcggcttcagcgcgcgcatccccagcctgttcgagtccctcttgccgtccttgctcaactacctctacccattcgccggccgcctcgtcaccaacccaagctccggcctccccgaactccactgccataaccaaggcgcagagctcgtggtcggcgaggtcggcgtcgccctggggagcctcaactacggcgcgaccaaggattccttcaagaagatggtgctcccgttccccagggacgtccttctgtcggtgcagctgctctccttcgcgtgcgggggcttctccgtcatgtggtggatcaaccacctcgtcggcgacggccacgtgggcgccacgatcgtcaggacgtggtcccagctcgcgcggaccggggacatcggcggtgcgcccccgctcaactacgaccgctccgtgttccgcccgcgcagcccgccgtcgtacagcgactccgtcgcggccaccttcacaacgttcgacgagaagcgcctgcccaacgccctcacggcggaggccagcttcgtggaccgcgtctactacgtggaggcgagcgacatcgccgcgctgcgcgacacggcggcggcggccaccacggcccagcgcccgacccgcgtcgaggcgctgtccgcctacctgtggaaggcgctcgccgacgtcgtggccgcgtgcccccggagcaacaaggagcgctgccgcatgggttggtgggtcagcgcgcggcgccgtgtcacggcgcctaagctcgtcgctttgatgcccggctacctggggaacgtgacgacctacgccctgggcgacgcgccggcggaggagatcgtgcggaagcctctggcggaggtggcggccatggtgcgggacgccatcacgtcggtggactacgacgagtacctccaggagatggtggactgggtggaggtgcacaagacggaaggcctgatggaggcggccgtcatcggagtcggcgcgcccacgctgaaccagtcggtgatgaccacgttcccgctcgacaccgacttcggcttcggccaggctactctggcaaccacggtctctgactatggcaggctttgctcggctttcctttcggtcggagcgcggccgggaggcgacggctcctggctcgtcaccgcctacatatggccgcagctggcggcggcgctggagtccgacggcatcttcaagcttctcacggcggagtacctcggtctagctatgtgagcaactgaacggaacacagttagctcgacggatcgatcatatatgtgttttctttcttttgattcgaatcgatgcatgatgtgcttcctttgtttttctgtcagcttttgtacctgtacgccagcagatgagactctggtctttgggatattatatatctgctaaataaagatgagctcgac

SEQ ID NO: 112015 - protein, 462 aa, Zea mays subsp. mays
  misc_feature (1)..(462): Ceres Seq. ID no. 15227140
  misc_feature (13)..(261): Pfam Name: Transferase family Pfam Description: Transferase family
  misc_feature (6)..(436): Homolog of NCBI NO: 15223333 NR Description: acyltransferase family [Arabidopsis thaliana]
  misc_feature (29)..(458): Homolog of NCBI NO: 32488821 NR Description: OSJNBa0085I10.1 [Oryza sativa (japonica
  misc_feature (12)..(458): Homolog of NCBI NO: 38567901 NR Description: OSJNBa0060N03.21 [Oryza sativa (japonica
  misc_feature (153)..(343): Homolog of NCBI NO: 34905186 NR Description: P0498E12.11 [Oryza sativa (japonica
  misc_feature (20)..(460): Homolog of NCBI NO: 15222365 NR Description: anthranilate
  misc_feature (103)..(123): Homolog of NCBI NO: 34393204 NR Description: anthranilate
  misc_feature (2)..(31): Homolog of NCBI NO: 34393204 NR Description: anthranilate
  misc_feature (137)..(436): Homolog of NCBI NO: 34393204 NR Description: anthranilate
  misc_feature (239)..(460): Homolog of NCBI NO: 34903004 NR Description: unnamed protein product [Oryza sativa (japonica
  misc_feature (13)..(261): Homolog of NCBI NO: 34903004 NR Description: unnamed protein product [Oryza sativa (japonica
MATTMAANDPTSIRVVSRRLVKASDASIQPHVMSLSNLDLYVCDSQLGTLCVYPNAGGGFSARIPSLFESLLPSLLNYLYPFAGRLVTNPSSGLPELHCHNQGAELVVGEVGVALGSLNYGATKDSFKKMVLPFPRDVLLSVQLLSFACGGFSVMWWINHLVGDGHVGATIVRTWSQLARTGDIGGAPPLNYDRSVFRPRSPPSYSDSVAATFTTFDEKRLPNALTAEASFVDRVYYVEASDIAALRDTAAAATTAQRPTRVEALSAYLWKALADVVAACPRSNKERCRMGWWVSARRRVTAPKLVALMPGYLGNVTTYALGDAPAEEIVRKPLAEVAAMVRDAITSVDYDEYLQEMVDWVEVHKTEGLMEAAVIGVGAPTLNQSVMTTFPLDTDFGFGQATLATTVSDYGRLCSAFLSVGARPGGDGSWLVTAYIWPQLAAALESDGIFKLLTAEYLGLAM

SEQ ID NO: 112016 - protein, 458 aa, Zea mays subsp. mays
  misc_feature (1)..(458): Ceres Seq. ID no. 15227141
  misc_feature (9)..(257): Pfam Name: Transferase family Pfam Description: Transferase family
  misc_feature (2)..(432): Homolog of NCBI NO: 15223333 NR Description: acyltransferase family [Arabidopsis thaliana]
  misc_feature (25)..(454): Homolog of NCBI NO: 32488821 NR Description: OSJNBa0085I10.1 [Oryza sativa (japonica
  misc_feature (8)..(454): Homolog of NCBI NO: 38567901 NR Description: OSJNBa0060N03.21 [Oryza sativa (japonica
  misc_feature (149)..(339): Homolog of NCBI NO: 34905186 NR Description: P0498E12.11 [Oryza sativa (japonica
  misc_feature (16)..(456): Homolog of NCBI NO: 15222365 NR Description: anthranilate
  misc_feature (99)..(119): Homolog of NCBI NO: 34393204 NR Description: anthranilate
  misc_feature (1)..(27): Homolog of NCBI NO: 34393204 NR Description: anthranilate
  misc_feature (133)..(432): Homolog of NCBI NO: 34393204 NR Description: anthranilate
  misc_feature (235)..(456): Homolog of NCBI NO: 34903004 NR Description: unnamed protein product [Oryza sativa (japonica
  misc_feature (9)..(257): Homolog of NCBI NO: 34903004 NR Description: unnamed protein product [Oryza sativa (japonica
MAANDPTSIRVVSRRLVKASDASIQPHVMSLSNLDLYVCDSQLGTLCVYPNAGGGFSARIPSLFESLLPSLLNYLYPFAGRLVTNPSSGLPELHCHNQGAELVVGEVGVALGSLNYGATKDSFKKMVLPFPRDVLLSVQLLSFACGGFSVMWWINHLVGDGHVGATIVRTWSQLARTGDIGGAPPLNYDRSVFRPRSPPSYSDSVAATFTTFDEKRLPNALTAEASFVDRVYYVEASDIAALRDTAAAATTAQRPTRVEALSAYLWKALADVVAACPRSNKERCRMGWWVSARRRVTAPKLVALMPGYLGNVTTYALGDAPAEEIVRKPLAEVAAMVRDAITSVDYDEYLQEMVDWVEVHKTEGLMEAAVIGVGAPTLNQSVMTTFPLDTDFGFGQATLATTVSDYGRLCSAFLSVGARPGGDGSWLVTAYIWPQLAAALESDGIFKLLTAEYLGLAM

SEQ ID NO: 112017 - protein, 430 aa, Zea mays subsp. mays
  misc_feature (1)..(430): Ceres Seq. ID no. 15227142
  misc_feature (1)..(229): Pfam Name: Transferase family Pfam Description: Transferase family
  misc_feature (1)..(426): Homolog of NCBI NO: 15219263 NR Description: acetyl-CoA:benzylalcohol acetyltranferase -
  misc_feature (1)..(404): Homolog of NCBI NO: 15223333 NR Description: acyltransferase family [Arabidopsis thaliana]
  misc_feature (1)..(426): Homolog of NCBI NO: 32488821 NR Description: OSJNBa0085I10.1 [Oryza sativa (japonica
  misc_feature (1)..(426): Homolog of NCBI NO: 38567901 NR Description: OSJNBa0060N03.21 [Oryza sativa (japonica
  misc_feature (121)..(311): Homolog of NCBI NO: 34905186 NR Description: P0498E12.11 [Oryza sativa (japonica
  misc_feature (1)..(428): Homolog of NCBI NO: 15222365 NR Description: anthranilate
  misc_feature (71)..(91): Homolog of NCBI NO: 34393204 NR Description: anthranilate
  misc_feature (105)..(404): Homolog of NCBI NO: 34393204 NR Description: anthranilate
  misc_feature (207)..(428): Homolog of NCBI NO: 34903004 NR Description: unnamed protein product [Oryza sativa (japonica
  misc_feature (1)..(229): Homolog of NCBI NO: 34903004 NR Description: unnamed protein product [Oryza sativa (japonica
MSLSNLDLYVCDSQLGTLCVYPNAGGGFSARIPSLFESLLPSLLNYLYPFAGRLVTNPSSGLPELHCHNQGAELVVGEVGVALGSLNYGATKDSFKKMVLPFPRDVLLSVQLLSFACGGFSVMWWINHLVGDGHVGATIVRTWSQLARTGDIGGAPPLNYDRSVFRPRSPPSYSDSVAATFTTFDEKRLPNALTAEASFVDRVYYVEASDIAALRDTAAAATTAQRPTRVEALSAYLWKALADVVAACPRSNKERCRMGWWVSARRRVTAPKLVALMPGYLGNVTTYALGDAPAEEIVRKPLAEVAAMVRDAITSVDYDEYLQEMVDWVEVHKTEGLMEAAVIGVGAPTLNQSVMTTFPLDTDFGFGQATLATTVSDYGRLCSAFLSVGARPGGDGSWLVTAYIWPQLAAALESDGIFKLLTAEYLGLAM

SEQ ID NO: 112018 - DNA, 765 bp, Zea mays subsp. mays
  misc_feature (1)..(765): Ceres Seq. ID no. 13623021
agaaagccgacgaaaaggcagagaaaagacgcacaccgaagaaaaacacaaagacttcatcatcatcatctcctccttctttcgcctcagcaagaagctaatctgattcagccatggctaatgcggcgtcaggaatggcagtccacgatgactgcaagctcaagtttcttgaattgaaggccaagaggacataccgtttcatcgtctacaagattgaggagcagcagaagcaagtggtcgttgagaaactcggcgagcctggtcaatcccatgatgactttgcagctagtcttcctgctgatgaatgccgatacgccattttcgattttgatttcgtcactgctgagaattgccaaaagagcaagatcttcttcgttgcatggtctccggacacggcaagagtgagaagcaagatgatctacgcgagctctaaggacaggttcaagagagagctagacgggattcaagtagagcttcaagcaaccgacccaaccgagatggatctcgacgttttcaaaagccgagccaattgaggaaccggttgaattgaacttctttcatctactattgccgagtgatatgcttttacttaaggtttgctgtgacggcaccaaccaaaaaacagcttcatttttatctgtctttggtctctgtctttattttattttggtccttacagtgttgtcttaaaacttaagaggtctggctcgtgctctaccctaaaccctctatcaaaaaatgaatcctattagcacattttgtctt

SEQ ID NO: 112019 - protein, 139 aa, Zea mays subsp. mays
  misc_feature (1)..(139): Ceres Seq. ID no. 13623022
  misc_feature (12)..(139): Pfam Name: Cofilin/tropomyosin-type actin-binding protein Pfam Description: Cofilin/tropomyosin-type actin-binding protein
  misc_feature (1)..(139): Homolog of NCBI NO: 38564721 NR Description: putative actin-depolymerizing factor 2
  misc_feature (8)..(139): Homolog of NCBI NO: 11276987 NR Description: actin depolymerizing factor 2 - Arabidopsis
  misc_feature (8)..(139): Homolog of NCBI NO: 30697303 NR Description: actin depolymerizing factor 4 - like protein
  misc_feature (1)..(139): Homolog of NCBI NO: 18408116 NR Description: actin depolymerizing factor 2 (ADF2) [Arabidopsis
  misc_feature (1)..(138): Homolog of NCBI NO: 17366765 NR Description: Actin-depolymerizing factor 2 (ADF 2)
  misc_feature (1)..(139): Homolog of NCBI NO: 17366768 NR Description: Actin-depolymerizing factor 1 (ADF 1)
  misc_feature (1)..(139): Homolog of NCBI NO: 4185511 NR Description: actin depolymerizing factor 4 [Arabidopsis
  misc_feature (1)..(139): Homolog of NCBI NO: 30697300 NR Description: actin depolymerizing factor 4 - like protein
  misc_feature (1)..(139): Homolog of NCBI NO: 15231309 NR Description: actin depolymerizing factor 1 (ADF1) [Arabidopsis
  misc_feature (1)..(139): Homolog of NCBI NO: 30697295 NR Description: actin depolymerizing factor 3 - like protein
MANAASGMAVHDDCKLKFLELKAKRTYRFIVYKIEEQQKQVVVEKLGEPGQSHDDFAASLPADECRYAIFDFDFVTAENCQKSKIFFVAWSPDTARVRSKMIYASSKDRFKRELDGIQVELQATDPTEMDLDVFKSRAN

SEQ ID NO: 112020 - protein, 132 aa, Zea mays subsp. mays
  misc_feature (1)..(132): Ceres Seq. ID no. 13623023
  misc_feature (5)..(132): Pfam Name: Cofilin/tropomyosin-type actin-binding protein Pfam Description: Cofilin/tropomyosin-type actin-binding protein
  misc_feature (1)..(132): Homolog of NCBI NO: 30697295 NR Description: actin depolymerizing factor 3 - like protein
  misc_feature (1)..(132): Homolog of NCBI NO: 38564721 NR Description: putative actin-depolymerizing factor 2
  misc_feature (1)..(132): Homolog of NCBI NO: 11276987 NR Description: actin depolymerizing factor 2 - Arabidopsis
  misc_feature (1)..(132): Homolog of NCBI NO: 30697303 NR Description: actin depolymerizing factor 4 - like protein
  misc_feature (1)..(132): Homolog of NCBI NO: 18408116 NR Description: actin depolymerizing factor 2 (ADF2) [Arabidopsis
  misc_feature (1)..(131): Homolog of NCBI NO: 17366765 NR Description: Actin-depolymerizing factor 2 (ADF 2)
  misc_feature (1)..(132): Homolog of NCBI NO: 17366768 NR Description: Actin-depolymerizing factor 1 (ADF 1)
  misc_feature (1)..(132): Homolog of NCBI NO: 4185511 NR Description: actin depolymerizing factor 4 [Arabidopsis
  misc_feature (1)..(132): Homolog of NCBI NO: 30697300 NR Description: actin depolymerizing factor 4 - like protein
  misc_feature (1)..(132): Homolog of NCBI NO: 15231309 NR Description: actin depolymerizing factor 1 (ADF1) [Arabidopsis
MAVHDDCKLKFLELKAKRTYRFIVYKIEEQQKQVVVEKLGEPGQSHDDFAASLPADECRYAIFDFDFVTAENCQKSKIFFVAWSPDTARVRSKMIYASSKDRFKRELDGIQVELQATDPTEMDLDVFKSRAN

SEQ ID NO: 112021 - DNA, 718 bp, Zea mays subsp. mays
  misc_feature (1)..(718): Ceres Seq. ID no. 15225557
gattcttcattcttccttccccttctctctcactacctactcctagcaacaacaatgagcttcttcatcgaagattctggtctcatcgtcacacaacttctctaccaaatggctgtcttaatcaccctcttgagatggatctttacttggatcttacgctaccgatccagatctacctcctcctcttcttcatctactcctccgatctcgtcacaaaccatcaaagagagcctcgccgtgacgacgttccgcgacgccgcggatcggtctccggaactgatcagcgacacttgcgcggtgtgtcttggagatttggaagacggagatgaggtcagagagctcagaaactgcagccacgtgttccaccgagagtgtatcgacaggtggctggactacgagtgctgtggcggagatgataacgacggcgaggaagataaccaccgcacgtgtcctctttgtagaactccgcttcttgctgctaatacgtcgtcgtgtgcggattggccggttaagaacgaacctagctgggccgttgagcggcttctctacctcttcggagatgatcttcttgtctgactttttattttatttttctttcgatatttatttgattttagtggagattgaaatttgttggtcgagttttgtaaattgggaatttaaagggtagaatagcatttatatataatatttcaattttaaacatattttctttgtg

SEQ ID NO: 112022 - protein, 191 aa, Zea mays subsp. mays
  misc_feature (1)..(191): Ceres Seq. ID no. 15225558
  misc_feature (98)..(153): Pfam Name: Zinc finger, C3HC4 type (RING finger) Pfam Description: Zinc finger, C3HC4 type (RING finger)
  misc_feature (59)..(168): Homolog of NCBI NO: 15233350 NR Description: RING-H2 finger protein RHA1b [Arabidopsis
  misc_feature (66)..(158): Homolog of NCBI NO: 15222553 NR Description: RING-H2 finger protein, putative [Arabidopsis
  misc_feature (68)..(159): Homolog of NCBI NO: 21554155 NR Description: RING zinc finger protein-like [Arabidopsis
  misc_feature (68)..(159): Homolog of NCBI NO: 15238072 NR Description: RING-H2 zinc finger protein, putative
  misc_feature (57)..(158): Homolog of NCBI NO: 18411282 NR Description: zinc finger (C3HC4-type RING finger) protein
  misc_feature (28)..(162): Homolog of NCBI NO: 23451086 NR Description: RING-H2 protein [Medicago sativa]
  misc_feature (49)..(158): Homolog of NCBI NO: 15233117 NR Description: BRH1 RING finger protein [Arabidopsis thaliana]
  misc_feature (69)..(174): Homolog of NCBI NO: 32488512 NR Description: OSJNBa0011J08.19 [Oryza sativa (japonica
  misc_feature (19)..(190): Homolog of NCBI NO: 15229284 NR Description: zinc finger (C3HC4-type RING finger) protein
  misc_feature (19)..(191): Homolog of NCBI NO: 18420336 NR Description: zinc finger (C3HC4-type RING finger) protein
DSSFFLPLLSHYLLLATTMSFFIEDSGLIVTQLLYQMAVLITLLRWIFTWILRYRSRSTSSSSSSTPPISSQTIKESLAVTTFRDAADRSPELISDTCAVCLGDLEDGDEVRELRNCSHVFHRECIDRWLDYECCGGDDNDGEEDNHRTCPLCRTPLLAANTSSCADWPVKNEPSWAVERLLYLFGDDLLV

SEQ ID NO: 112023 - protein, 173 aa, Zea mays subsp. mays; identical to SEQ ID NO: 61596
  misc_feature (1)..(173): Ceres Seq. ID no. 15225559
  misc_feature (80)..(135): Pfam Name: Zinc finger, C3HC4 type (RING finger) Pfam Description: Zinc finger, C3HC4 type (RING finger)
  misc_feature (41)..(150): Homolog of NCBI NO: 15233350 NR Description: RING-H2 finger protein RHA1b [Arabidopsis
  misc_feature (48)..(140): Homolog of NCBI NO: 15222553 NR Description: RING-H2 finger protein, putative [Arabidopsis
  misc_feature (50)..(141): Homolog of NCBI NO: 21554155 NR Description: RING zinc finger protein-like [Arabidopsis
  misc_feature (50)..(141): Homolog of NCBI NO: 15238072 NR Description: RING-H2 zinc finger protein, putative
  misc_feature (39)..(140): Homolog of NCBI NO: 18411282 NR Description: zinc finger (C3HC4-type RING finger) protein
  misc_feature (10)..(144): Homolog of NCBI NO: 23451086 NR Description: RING-H2 protein [Medicago sativa]
  misc_feature (31)..(140): Homolog of NCBI NO: 15233117 NR Description: BRH1 RING finger protein [Arabidopsis thaliana]
  misc_feature (51)..(156): Homolog of NCBI NO: 32488512 NR Description: OSJNBa0011J08.19 [Oryza sativa (japonica
  misc_feature (1)..(172): Homolog of NCBI NO: 15229284 NR Description: zinc finger (C3HC4-type RING finger) protein
  misc_feature (1)..(173): Homolog of NCBI NO: 18420336 NR Description: zinc finger (C3HC4-type RING finger) protein

SEQ ID NO: 112024 - protein, 155 aa, Zea mays subsp. mays; identical to SEQ ID NO: 61597
  misc_feature (1)..(155): Ceres Seq. ID no. 15225560
  misc_feature (62)..(117): Pfam Name: Zinc finger, C3HC4 type (RING finger) Pfam Description: Zinc finger, C3HC4 type (RING finger)
  misc_feature (23)..(132): Homolog of NCBI NO: 15233350 NR Description: RING-H2 finger protein RHA1b [Arabidopsis
  misc_feature (30)..(122): Homolog of NCBI NO: 15222553 NR Description: RING-H2 finger protein, putative [Arabidopsis
  misc_feature (32)..(123): Homolog of NCBI NO: 21554155 NR Description: RING zinc finger protein-like [Arabidopsis
  misc_feature (32)..(123): Homolog of NCBI NO: 15238072 NR Description: RING-H2 zinc finger protein, putative
  misc_feature (21)..(122): Homolog of NCBI NO: 18411282 NR Description: zinc finger (C3HC4-type RING finger) protein
  misc_feature (1)..(126): Homolog of NCBI NO: 23451086 NR Description: RING-H2 protein [Medicago sativa]
  misc_feature (13)..(122): Homolog of NCBI NO: 15233117 NR Description: BRH1 RING finger protein [Arabidopsis thaliana]
  misc_feature (33)..(138): Homolog of NCBI NO: 32488512 NR Description: OSJNBa0011J08.19 [Oryza sativa (japonica
  misc_feature (1)..(154): Homolog of NCBI NO: 15229284 NR Description: zinc finger (C3HC4-type RING finger) protein
  misc_feature (1)..(155): Homolog of NCBI NO: 18420336 NR Description: zinc finger (C3HC4-type RING finger) protein

SEQ ID NO: 112025 - DNA, 1243 bp, Zea mays subsp. mays
  misc_feature (1)..(1243): Ceres Seq. ID no. 13599524
agaagaccactatattctgcctctccgttctgttcttgccgtgttctatttttccgctctgctgtacatggcgtcggttgcaggcgaggggaggagccgggtgctggtgataggcggcacgggctacataggccgcttcatcgtcgccgccagcgcacgcgagggccaccccaccgccgtcctcgtccgcgacgccgcgcccgccgacccagccaaggccgccgtcctccagggattccgggatgccggcgtcaccatcgtcaagggtgatatgtatgatcatgagagcctggtgacagccattaaatcagcagatgttgtgatctcggccgtgggttatcaacagctaccggatcaaactctcattatctcggcaattaaggaagttgggcatgtaaagagattcttcccatcagagtatggtaatgatgtggatcgtaaccatgcagttgaacctgcaaagacagtattcggtgggaaagctcatataaggcgtgccattgaggctgaggggattccctacacatatgtctcttccaacttctttgctggtcgtttcttgcgaagccttgcgcagattggggtcacggagcctccaaccgagaaggttctcattatgggtgatggaaatgtaaaaggaatctttgcggcggaggaagacgtgggaacctacactattaaagctgtagatgatccaaggaccctgaacaaaatcctatatctgaggccaccaagtaacactttgtcccataatgagcttgtctcactctgggagaagaaacttggtaagacacttgagagggtgtacctcccagaggacgaactcctgaagaagattcgagagtcatcagcgccgctgaatgtagcactggcaatcagccactctgtctggttgaagggggaccacactaactttgagatcgacccatcatttggagttgaagccactcagctttaccctgatgtgccttacattaccgtggatgaatacctaaataggttcctttaaactcctaaatcctatcgtcgccaatattcatatactttgaataaatgttggaggttatgtatttttactagaatggcacgtgaattacgtaatcagagtgtgagacctcaatcatgtgaggaatgcatcttgcattcccttgagcttagaatatataaactgaggttgtataaatttggaaattttagcttgatggaacatgataccgtatgtaacagcccgggggtttacgcc

SEQ ID NO: 112026 - protein, 335 aa, Zea mays subsp. mays
  misc_feature (1)..(335): Ceres Seq. ID no. 13599525
  misc_feature (31)..(335): Pfam Name: Isoflavone reductase Pfam Description: Isoflavone reductase
  misc_feature (31)..(335): Homolog of NCBI NO: 3243234 NR Description: isoflavone reductase related protein [Pyrus
EDHYILPLRSVLAVFYFSALLYMASVAGEGRSRVLVIGGTGYIGRFIVAASAREGHPTAVLVRDAAPADPAKAAVLQGFRDAGVTIVKGDMYDHESLVTAIKSADVVISAVGYQQLPDQTLIISAIKEVGHVKRFFPSEYGNDVDRNHAVEPAKTVFGGKAHIRRAIEAEGIPYTYVSSNFFAGRFLRSLAQIGVTEPPTEKVLIMGDGNVKGIFAAEEDVGTYTIKAVDDPRTLNKILYLRPPSNTLSHNELVSLWEKKLGKTLERVYLPEDELLKKIRESSAPLNVALAISHSVWLKGDHTNFEIDPSFGVEATQLYPDVPYITVDEYLNRFL

SEQ ID NO: 112027 - protein, 313 aa, Zea mays subsp. mays
  misc_feature (1)..(313): Ceres Seq. ID no. 13599526
  misc_feature (9)..(313): Pfam Name: Isoflavone reductase Pfam Description: Isoflavone reductase
  misc_feature (9)..(313): Homolog of NCBI NO: 3243234 NR Description: isoflavone reductase related protein [Pyrus
MASVAGEGRSRVLVIGGTGYIGRFIVAASAREGHPTAVLVRDAAPADPAKAAVLQGFRDAGVTIVKGDMYDHESLVTAIKSADVVISAVGYQQLPDQTLIISAIKEVGHVKRFFPSEYGNDVDRNHAVEPAKTVFGGKAHIRRAIEAEGIPYTYVSSNFFAGRFLRSLAQIGVTEPPTEKVLIMGDGNVKGIFAAEEDVGTYTIKAVDDPRTLNKILYLRPPSNTLSHNELVSLWEKKLGKTLERVYLPEDELLKKIRESSAPLNVALAISHSVWLKGDHTNFEIDPSFGVEATQLYPDVPYITVDEYLNRFL

SEQ ID NO: 112028 - protein, 245 aa, Zea mays subsp. mays
  misc_feature (1)..(245): Ceres Seq. ID no. 13599527
  misc_feature (1)..(245): Pfam Name: Isoflavone reductase Pfam Description: Isoflavone reductase
  misc_feature (1)..(245): Homolog of NCBI NO: 3243234 NR Description: isoflavone reductase related protein [Pyrus
MYDHESLVTAIKSADVVISAVGYQQLPDQTLIISAIKEVGHVKRFFPSEYGNDVDRNHAVEPAKTVFGGKAHIRRAIEAEGIPYTYVSSNFFAGRFLRSLAQIGVTEPPTEKVLIMGDGNVKGIFAAEEDVGTYTIKAVDDPRTLNKILYLRPPSNTLSHNELVSLWEKKLGKTLERVYLPEDELLKKIRESSAPLNVALAISHSVWLKGDHTNFEIDPSFGVEATQLYPDVPYITVDEYLNRFL

SEQ ID NO: 112029 - DNA, 887 bp, Zea mays subsp. mays
  misc_feature (1)..(887): Ceres Seq. ID no. 12635796
atcatctgcttaaaatcccccatcgcttcggacattagcttaaagtctttctccttcacctaccattctctctctctctctctcccctttcgtacctctcgacagagagagtgaaatgacttggtccgtcttcagatccataaactctccaactctcgacctctccgccgcacttcgctccacccgcagccctttgttcgccgccggtgcaggctgcgctaccctcgctggtgtttctctcttccgaatgtcttccagatctcctcctttcgcttctctcagtgtctcagcttctgcttctgagaagaaggaagttgtggcgacagagaaagcaccagctgctttgggaccatactctcaggccatcaaagccaacaatctcgttttcgtttccggtgttcttggtcttatacctgagactggaaagtttgtttcggacaacgttgaagatcagactgagcagatactcaagaacatgggggagatactgaaagctagtggtgttgattactcctccgtggtgaagacaacgatcatgcttgctgacttaggtgacttcaagaaagtgaacgagatttacgccaaatacttcccagctccttcaccagcgcgatcgacatatcaagtcgcagctttgccactaaacgccaagattgagattgaatgtattgcagcactctagagcaccatcaaatctcatccaggaagagttttagattcggaaaatgtcagaacaaataagaggggcttatcatatcaaccattaggttggttgtaaaacccatacccctatcaagaataagtgattctattttaggaccagcatgttgtgttgacttgatatttattgagtacaatattaaatttgaaaccaaaaaaaaaaaaaa

SEQ ID NO: 112030 - protein, 188 aa, Zea mays subsp. mays
  misc_feature (1)..(188): Ceres Seq. ID no. 12635797
  misc_feature (70)..(188): Pfam Name: Endoribonuclease L-PSP Pfam Description: Endoribonuclease L-PSP
  misc_feature (65)..(186): Homolog of NCBI NO: 25148891 NR Description: YjgF family precursor [Caenorhabditis elegans]
  misc_feature (65)..(188): Homolog of NCBI NO: 40807498 NR Description: heat-responsive protein 12 [Mus musculus]
  misc_feature (57)..(188): Homolog of NCBI NO: 1708292 NR Description: HEAT-RESPONSIVE PROTEIN 12
  misc_feature (65)..(186): Homolog of NCBI NO: 39579795 NR Description: Hypothetical protein CBG24261 [Caenorhabditis
  misc_feature (65)..(186): Homolog of NCBI NO: 30584193 NR Description: Homo sapiens translational inhibitor protein
  misc_feature (65)..(186): Homolog of NCBI NO: 5032215 NR Description: translational inhibitor protein p14.5 [Homo
  misc_feature (1)..(188): Homolog of NCBI NO: 23617012 NR Description: putative translational inhibitor protein
  misc_feature (11)..(188): Homolog of NCBI NO: 29420485 NR Description: translation-inhibitor protein [Gentiana triflora]
  misc_feature (45)..(188): Homolog of NCBI NO: 9294558 NR Description: contains similarity to protein translation
  misc_feature (1)..(188): Homolog of NCBI NO: 15231137 NR Description: translational inhibitor protein, putative
MTWSVFRSINSPTLDLSAALRSTRSPLFAAGAGCATLAGVSLFRMSSRSPPFASLSVSASASEKKEVVATEKAPAALGPYSQAIKANNLVFVSGVLGLIPETGKFVSDNVEDQTEQILKNMGEILKASGVDYSSVVKTTIMLADLGDFKKVNEIYAKYFPAPSPARSTYQVAALPLNAKIEIECIAAL

SEQ ID NO: 112031 - protein, 144 aa, Zea mays subsp. mays
  misc_feature (1)..(144): Ceres Seq. ID no. 12635798
  misc_feature (26)..(144): Pfam Name: Endoribonuclease L-PSP Pfam Description: Endoribonuclease L-PSP
  misc_feature (21)..(142): Homolog of NCBI NO: 25148891 NR Description: YjgF family precursor [Caenorhabditis elegans]
  misc_feature (21)..(144): Homolog of NCBI NO: 40807498 NR Description: heat-responsive protein 12 [Mus musculus]
  misc_feature (13)..(144): Homolog of NCBI NO: 1708292 NR Description: HEAT-RESPONSIVE PROTEIN 12
  misc_feature (21)..(142): Homolog of NCBI NO: 39579795 NR Description: Hypothetical protein CBG24261 [Caenorhabditis
  misc_feature (21)..(142): Homolog of NCBI NO: 30584193 NR Description: Homo sapiens translational inhibitor protein
  misc_feature (21)..(142): Homolog of NCBI NO: 5032215 NR Description: translational inhibitor protein p14.5 [Homo
  misc_feature (1)..(144): Homolog of NCBI NO: 23617012 NR Description: putative translational inhibitor protein
  misc_feature (1)..(144): Homolog of NCBI NO: 29420485 NR Description: translation-inhibitor protein [Gentiana triflora]
  misc_feature (1)..(144): Homolog of NCBI NO: 9294558 NR Description: contains similarity to protein translation
  misc_feature (1)..(144): Homolog of NCBI NO: 15231137 NR Description: translational inhibitor protein, putative
MSSRSPPFASLSVSASASEKKEVVATEKAPAALGPYSQAIKANNLVFVSGVLGLIPETGKFVSDNVEDQTEQILKNMGEILKASGVDYSSVVKTTIMLADLGDFKKVNEIYAKYFPAPSPARSTYQVAALPLNAKIEIECIAAL

SEQ ID NO: 112032 - DNA, 948 bp, Zea mays subsp. mays
  misc_feature (1)..(948): Ceres Seq. ID no. 12635639
aacctttattttgtttctgccaaacacttctcttcctctctccaatggcttcctccttatccttcgtctcatcctctcacctcactctccgcactccttccctcaccctacgcaaactctctccccctagaacctccgtttcgttctccgtcaaggcccagtccgtcgcactctcccaagacgatctcaagaaactcgcggcggagaaagccgtggaggcgatcaaaccggggatggtcctcggcctcggaaccggatccaccgccgccttcgccgtcgaccaaatcggaaaactcctctcctccggcgagctccacgacatcgtcggcatcccgacctcaaaacgcaccgaggagcaggccagatccctagggatccccctcgtggccctggacacgcatcctcggatcgacctggccatcgacggagcggacgaggtggatccgaatctggacctggtcaaggggcgaggaggcgcgctcctgagggagaagatggtggaggccgtggccgagagatttatcgtcgttgcggatgatacgaagctagtgaaggggctgggagggagtggtttagcgatgcctgtggaggttgttcagttctgctggaagtttaatttggtgaggctgagggatttgtttaaggagtttgggtgcgatgcgaagctgagggttggtgagggtggggaggcgtatgtgacggataatagtaattatattattgatttgtattttaaggagccgttgaaggatgggttcgctgcggggagggagattgggaagttggagggggttgtggagcatggtttgtttttggggatggctacttcggtgattattgctgggaagaatggtgttgaggttatgaacaagtgaggtttttttaaaagtttgatgtttttcttctttgtctcctctgtaataatattaccaattgagttattgtaat

SEQ ID NO: 112033 - protein, 290 aa, Zea mays subsp. mays
  misc_feature (1)..(290): Ceres Seq. ID no. 12635640
  misc_feature (107)..(286): Pfam Name: Ribose 5-phosphate isomerase A (phosphoriboisomerase A) Pfam Description: Ribose 5-phosphate isomerase A
  misc_feature (57)..(290): Homolog of NCBI NO: 38347196 NR Description: OSJNBa0023J03.8 [Oryza sativa (japonica
  misc_feature (57)..(290): Homolog of NCBI NO: 13430836 NR Description: putative ribose 5-phosphate isomerase
  misc_feature (57)..(290): Homolog of NCBI NO: 15223936 NR Description: putative ribose 5-phosphate isomerase
  misc_feature (57)..(290): Homolog of NCBI NO: 21592672 NR Description: putative ribose 5-phosphate isomerase
  misc_feature (53)..(290): Homolog of NCBI NO: 15226223 NR Description: putative ribose 5-phosphate isomerase
  misc_feature (12)..(290): Homolog of NCBI NO: 18654317 NR Description: ribose-5-phosphate isomerase [Spinacia oleracea]
  misc_feature (45)..(290): Homolog of NCBI NO: 34393836 NR Description: putative ribose-5-phosphate isomerase
  misc_feature (37)..(290): Homolog of NCBI NO: 34393835 NR Description: putative ribose-5-phosphate isomerase
  misc_feature (17)..(290): Homolog of NCBI NO: 21594002 NR Description: putative ribose 5-phosphate isomerase
  misc_feature (17)..(290): Homolog of NCBI NO: 15229349 NR Description: putative ribose 5-phosphate isomerase
PLFCFCQTLLFLSPMASSLSFVSSSHLTLRTPSLTLRKLSPPRTSVSFSVKAQSVALSQDDLKKLAAEKAVEAIKPGMVLGLGTGSTAAFAVDQIGKLLSSGELHDIVGIPTSKRTEEQARSLGIPLVALDTHPRIDLAIDGADEVDPNLDLVKGRGGALLREKMVEAVAERFIVVADDTKLVKGLGGSGLAMPVEVVQFCWKFNLVRLRDLFKEFGCDAKLRVGEGGEAYVTDNSNYIIDLYFKEPLKDGFAAGREIGKLEGVVEHGLFLGMATSVIIAGKNGVEVMNK

SEQ ID NO: 112034 - protein, 276 aa, Zea mays subsp. mays
  misc_feature (1)..(276): Ceres Seq. ID no. 12635641
  misc_feature (93)..(272): Pfam Name: Ribose 5-phosphate isomerase A (phosphoriboisomerase A) Pfam Description: Ribose 5-phosphate isomerase A
  misc_feature (39)..(276): Homolog of NCBI NO: 15226223 NR Description: putative ribose 5-phosphate isomerase
  misc_feature (1)..(276): Homolog of NCBI NO: 18654317 NR Description: ribose-5-phosphate isomerase [Spinacia oleracea]
  misc_feature (31)..(276): Homolog of NCBI NO: 34393836 NR Description: putative ribose-5-phosphate isomerase
  misc_feature (43)..(276): Homolog of NCBI NO: 38347196 NR Description: OSJNBa0023J03.8 [Oryza sativa (japonica
  misc_feature (43)..(276): Homolog of NCBI NO: 15223936 NR Description: putative ribose 5-phosphate isomerase
  misc_feature (43)..(276): Homolog of NCBI NO: 21592672 NR Description: putative ribose 5-phosphate isomerase
  misc_feature (43)..(276): Homolog of NCBI NO: 13430836 NR Description: putative ribose 5-phosphate isomerase
  misc_feature (23)..(276): Homolog of NCBI NO: 34393835 NR Description: putative ribose-5-phosphate isomerase
  misc_feature (3)..(276): Homolog of NCBI NO: 21594002 NR Description: putative ribose 5-phosphate isomerase
  misc_feature (3)..(276): Homolog of NCBI NO: 15229349 NR Description: putative ribose 5-phosphate isomerase
MASSLSFVSSSHLTLRTPSLTLRKLSPPRTSVSFSVKAQSVALSQDDLKKLAAEKAVEAIKPGMVLGLGTGSTAAFAVDQIGKLLSSGELHDIVGIPTSKRTEEQARSLGIPLVALDTHPRIDLAIDGADEVDPNLDLVKGRGGALLREKMVEAVAERFIVVADDTKLVKGLGGSGLAMPVEVVQFCWKFNLVRLRDLFKEFGCDAKLRVGEGGEAYVTDNSNYIIDLYFKEPLKDGFAAGREIGKLEGVVEHGLFLGMATSVIIAGKNGVEVMNK

SEQ ID NO: 112035 - protein, 213 aa, Zea mays subsp. mays
  misc_feature (1)..(213): Ceres Seq. ID no. 12635642
  misc_feature (30)..(209): Pfam Name: Ribose 5-phosphate isomerase A (phosphoriboisomerase A) Pfam Description: Ribose 5-phosphate isomerase A
  misc_feature (1)..(213): Homolog of NCBI NO: 38347196 NR Description: OSJNBa0023J03.8 [Oryza sativa (japonica
  misc_feature (1)..(213): Homolog of NCBI NO: 13430836 NR Description: putative ribose 5-phosphate isomerase
  misc_feature (1)..(213): Homolog of NCBI NO: 15223936 NR Description: putative ribose 5-phosphate isomerase
  misc_feature (1)..(213): Homolog of NCBI NO: 21592672 NR Description: putative ribose 5-phosphate isomerase
  misc_feature (1)..(213): Homolog of NCBI NO: 15226223 NR Description: putative ribose 5-phosphate isomerase
  misc_feature (1)..(213): Homolog of NCBI NO: 18654317 NR Description: ribose-5-phosphate isomerase [Spinacia oleracea]
  misc_feature (1)..(213): Homolog of NCBI NO: 34393836 NR Description: putative ribose-5-phosphate isomerase
  misc_feature (1)..(213): Homolog of NCBI NO: 34393835 NR Description: putative ribose-5-phosphate isomerase
  misc_feature (1)..(213): Homolog of NCBI NO: 21594002 NR Description: putative ribose 5-phosphate isomerase
  misc_feature (1)..(213): Homolog of NCBI NO: 15229349 NR Description: putative ribose 5-phosphate isomerase
MVLGLGTGSTAAFAVDQIGKLLSSGELHDIVGIPTSKRTEEQARSLGIPLVALDTHPRIDLAIDGADEVDPNLDLVKGRGGALLREKMVEAVAERFIVVADDTKLVKGLGGSGLAMPVEVVQFCWKFNLVRLRDLFKEFGCDAKLRVGEGGEAYVTDNSNYIIDLYFKEPLKDGFAAGREIGKLEGVVEHGLFLGMATSVIIAGKNGVEVMNK

SEQ ID NO: 112036 - DNA, 796 bp, Zea mays subsp. mays
  misc_feature (1)..(796): Ceres Seq. ID no. 12635789
gaacctctctgcctcttttgaccaaaaaaaacaaaagctctgtgcctctttgcagcgaaagctctatcaacaagacgatgattatctcagagaccaaccgcagagagatctgcaagtacctcttcaaagaaggagtattgtttgcgaagaaagatttcaatctcccgaagcatccgttgattgagtcagtgcccaacttgcaagtgatcaagctcatgcagagtttcaagtccaaggagtacgttagggagacattcgcgtggatgcactactattggtttctgaccaacgaagggattgagttcttgagaacttatcttaaccttccgtctgatgttgttcctgcgactttgaagaagtctgctaagcccattggtcgtcccttcggtggcccacctggtgatcgcccaagaggaccacctcgctttgatggagaccgtccaagatatggtgaccgtgatggttaccgtggagggcagcgtggtggtgatgttggaggtgaaaagggtggagctcctgctgattaccagccctcgttccaaggaggtggtggtaggcctggatttggccgtggcgcaggaggtttcagcgcagcagcaccctctggttctggtttaccttgaaagaaatttatgtaatcgttaagctatggaaagactgtttttttttttttttttttggcttcagttttgtttctgtaatacacatcgggaatctataatctatctatttctatgacttttggtctaaagaaacaaatcttatagttgaattcttgttgaaatgcacgtttctt

SEQ ID NO: 112037 - protein, 206 aa, Zea mays subsp. mays
  misc_feature (1)..(206): Ceres Seq. ID no. 12635790
  misc_feature (28)..(123): Pfam Name: Plectin/S10 domain Pfam Description: Plectin/S10 domain
  misc_feature (26)..(192): Homolog of NCBI NO: 28200289 NR Description: ribosomal protein S10 [Branchiostoma belcheri
  misc_feature (26)..(192): Homolog of NCBI NO: 24266976 NR Description: ribosomal protein S10 [Branchiostoma belcheri]
  misc_feature (26)..(200): Homolog of NCBI NO: 40642980 NR Description: ribosomal protein S10 [Crassostrea gigas]
  misc_feature (26)..(201): Homolog of NCBI NO: 34905824 NR Description: putative ribosomal protein S10
  misc_feature (26)..(205): Homolog of NCBI NO: 20140213 NR Description: 40S ribosomal protein S10
  misc_feature (26)..(205): Homolog of NCBI NO: 34897532 NR Description: OSJNBa0042L16.3 [Oryza sativa (japonica
  misc_feature (26)..(206): Homolog of NCBI NO: 15238099 NR Description: putative protein
  misc_feature (26)..(206): Homolog of NCBI NO: 20139798 NR Description: 40S ribosomal protein S10-3
  misc_feature (26)..(206): Homolog of NCBI NO: 15237217 NR Description: putative protein
  misc_feature (26)..(206): Homolog of NCBI NO: 15235985 NR Description: putative ribosomal protein S10
TSLPLLTKKNKSSVPLCSESSINKTMIISETNRREICKYLFKEGVLFAKKDFNLPKHPLIESVPNLQVIKLMQSFKSKEYVRETFAWMHYYWFLTNEGIEFLRTYLNLPSDVVPATLKKSAKPIGRPFGGPPGDRPRGPPRFDGDRPRYGDRDGYRGGQRGGDVGGEKGGAPADYQPSFQGGGGRPGFGRGAGGFSAAAPSGSGLP

SEQ ID NO: 112038 - protein, 181 aa, Zea mays subsp. mays
  misc_feature (1)..(181): Ceres Seq. ID no. 12635791
  misc_feature (3)..(98): Pfam Name: Plectin/S10 domain Pfam Description: Plectin/S10 domain
  misc_feature (1)..(167): Homolog of NCBI NO: 28200289 NR Description: ribosomal protein S10 [Branchiostoma belcheri
  misc_feature (1)..(167): Homolog of NCBI NO: 24266976 NR Description: ribosomal protein S10 [Branchiostoma belcheri]
  misc_feature (1)..(175): Homolog of NCBI NO: 40642980 NR Description: ribosomal protein S10 [Crassostrea gigas]
  misc_feature (1)..(176): Homolog of NCBI NO: 34905824 NR Description: putative ribosomal protein S10
  misc_feature (1)..(180): Homolog of NCBI NO: 20140213 NR Description: 40S ribosomal protein S10
  misc_feature (1)..(180): Homolog of NCBI NO: 34897532 NR Description: OSJNBa0042L16.3 [Oryza sativa (japonica
  misc_feature (1)..(181): Homolog of NCBI NO: 15238099 NR Description: putative protein
  misc_feature (1)..(181): Homolog of NCBI NO: 20139798 NR Description: 40S ribosomal protein S10-3
  misc_feature (1)..(181): Homolog of NCBI NO: 15237217 NR Description: putative protein
  misc_feature (1)..(181): Homolog of NCBI NO: 15235985 NR Description: putative ribosomal protein S10
MIISETNRREICKYLFKEGVLFAKKDFNLPKHPLIESVPNLQVIKLMQSFKSKEYVRETFAWMHYYWFLTNEGIEFLRTYLNLPSDVVPATLKKSAKPIGRPFGGPPGDRPRGPPRFDGDRPRYGDRDGYRGGQRGGDVGGEKGGAPADYQPSFQGGGGRPGFGRGAGGFSAAAPSGSGLP

SEQ ID NO: 112039 - protein, 135 aa, Zea mays subsp. mays
  misc_feature (1)..(135): Ceres Seq. ID no. 12635792
  misc_feature (1)..(52): Pfam Name: Plectin/S10 domain Pfam Description: Plectin/S10 domain
  misc_feature (1)..(121): Homolog of NCBI NO: 28200289 NR Description: ribosomal protein S10 [Branchiostoma belcheri
  misc_feature (1)..(121): Homolog of NCBI NO: 24266976 NR Description: ribosomal protein S10 [Branchiostoma belcheri]
  misc_feature (1)..(129): Homolog of NCBI NO: 40642980 NR Description: ribosomal protein S10 [Crassostrea gigas]
  misc_feature (1)..(130): Homolog of NCBI NO: 34905824 NR Description: putative ribosomal protein S10
  misc_feature (1)..(134): Homolog of NCBI NO: 20140213 NR Description: 40S ribosomal protein S10
  misc_feature (1)..(134): Homolog of NCBI NO: 34897532 NR Description: OSJNBa0042L16.3 [Oryza sativa (japonica
  misc_feature (1)..(135): Homolog of NCBI NO: 15238099 NR Description: putative protein
  misc_feature (1)..(135): Homolog of NCBI NO: 20139798 NR Description: 40S ribosomal protein S10-3
  misc_feature (1)..(135): Homolog of NCBI NO: 15237217 NR Description: putative protein
  misc_feature (1)..(135): Homolog of NCBI NO: 15235985 NR Description: putative ribosomal protein S10
MQSFKSKEYVRETFAWMHYYWFLTNEGIEFLRTYLNLPSDVVPATLKKSAKPIGRPFGGPPGDRPRGPPRFDGDRPRYGDRDGYRGGQRGGDVGGEKGGAPADYQPSFQGGGGRPGFGRGAGGFSAAAPSGSGLP

SEQ ID NO: 112040 - DNA, 968 bp, Zea mays subsp. mays
  misc_feature (1)..(968): Ceres Seq. ID no. 13599200
agacattcttcttcgcatcggtttgttgcttagccagagctctgcttagcttcatcagagaagctcttctcccgtaagttgtttgaatctcagctccaactccagatctcactttcgccatctcttgaaaatctatttggtttttcaagaatcgcaaatggacggaagcggcggcggtggtggttctttagccacacctgttcaaaagcgggctcacgaggcgtggaggatttacaagtattacctcgacaagactacgcctcactcgacctacaggtggatcgggacgcttgtcgtctttctcatctactccttgagggttttctctattcacggtttctacatcatctcctacgccctcggcatctacctcttgaacctcctcatcggcttcttgtcccctcttgttgatcctgagctcgacctctcctctgatggtggaccttctctccctactcgaggctctgatgagttcaagccttttatccgccgtctccccgagttcaaattctggttttctatttaattatgcacttaacatgtttttttttttttttgtttatttggatggggattgaatctgtttttcaggtactccatgactaaggccttctgcattgcgtttctgatgacgttcttctccgtctttgatgttcctgtcttctggcctattctgctttgctactgggttgttctctttttcctcaccatgagacgccaaatctcccacatgatcaagcacaagtacatccccttcagcatcggtaaacagaaatatagtggccggagatcttctgcgagtagcggtcgtgctgattgattctgattattagttccaatttgtttcatgttgctctctgttagttccctccaaagtacctcttctgtaaatatgattcatttctacttcaaaaaaaaaaaaamaaaagcttatcgatatccgtcgacctsgagggggggcccggtgc

SEQ ID NO: 112041 - protein, 122 aa, Zea mays subsp. mays
  misc_feature (1)..(122): Ceres Seq. ID no. 15222535
  misc_feature (6)..(122): Pfam Name: Rer1 family Pfam Description: Rer1 family
  misc_feature (24)..(119): Homolog of NCBI NO: 7688699 NR Description: RER1 protein [Homo sapiens]
  misc_feature (24)..(119): Homolog of NCBI NO: 6226763 NR Description: RER1 PROTEIN
  misc_feature (1)..(122): Homolog of NCBI NO: 15234975 NR Description: AtRer1A [Arabidopsis thaliana]
  misc_feature (1)..(122): Homolog of NCBI NO: 15226596 NR Description: AtRer1B [Arabidopsis thaliana]
  misc_feature (1)..(122): Homolog of NCBI NO: 11281669 NR Description: endoplasmatic reticulum retrieval protein Rer1B
  misc_feature (10)..(122): Homolog of NCBI NO: 7488292 NR Description: probable integral membrane protein At2g23310
  misc_feature (10)..(122): Homolog of NCBI NO: 30682033 NR Description: integral membrane protein -related [Arabidopsis
  misc_feature (10)..(122): Homolog of NCBI NO: 18400234 NR Description: integral membrane protein -related [Arabidopsis
  misc_feature (2)..(120): Homolog of NCBI NO: 35210534 NR Description: putative endoplasmatic reticulum retrieval
  misc_feature (1)..(122): Homolog of NCBI NO: 34894094 NR Description: putative Rer1A protein (AtRer1A)
MDGSGGGGGSLATPVQKRAHEAWRIYKYYLDKTTPHSTYRWIGTLVVFLIYSLRVFSIHGFYIISYALGIYLLNLLIGFLSPLVDPELDLSSDGGPSLPTRGSDEFKPFIRRLPEFKFWFSI

SEQ ID NO: 112042 - protein, 73 aa, Zea mays subsp. mays
  misc_feature (1)..(73): Ceres Seq. ID no. 15222536
  misc_feature (1)..(59): Pfam Name: Rer1 family Pfam Description: Rer1 family
  misc_feature (1)..(73): Homolog of NCBI NO: 11281669 NR Description: endoplasmatic reticulum retrieval protein Rer1B
  misc_feature (1)..(62): Homolog of NCBI NO: 29840922 NR Description: similar to GenBank Accession Number AF157324 RER1
  misc_feature (1)..(63): Homolog of NCBI NO: 13385882 NR Description: similar to S. cerevisiae RER1 [Mus musculus]
  misc_feature (1)..(69): Homolog of NCBI NO: 6226763 NR Description: RER1 PROTEIN
  misc_feature (1)..(72): Homolog of NCBI NO: 7688699 NR Description: RER1 protein [Homo sapiens]
  misc_feature (1)..(58): Homolog of NCBI NO: 7488292 NR Description: probable integral membrane protein At2g23310
  misc_feature (1)..(69): Homolog of NCBI NO: 30682033 NR Description: integral membrane protein -related [Arabidopsis
  misc_feature (1)..(69): Homolog of NCBI NO: 18400234 NR Description: integral membrane protein -related [Arabidopsis
  misc_feature (1)..(58): Homolog of NCBI NO: 35210534 NR Description: putative endoplasmatic reticulum retrieval
  misc_feature (1)..(59): Homolog of NCBI NO: 34894094 NR Description: putative Rer1A protein (AtRer1A)
MTKAFCIAFLMTFFSVFDVPVFWPILLCYWVVLFFLTMRRQISHMIKHKYIPFSIGKQKYSGRRSSASSGRAD

SEQ ID NO: 112043 - protein, 63 aa, Zea mays subsp. mays
  misc_feature (1)..(63): Ceres Seq. ID no. 15222537
  misc_feature (1)..(63): Homolog of NCBI NO: 11281669 NR Description: endoplasmatic reticulum retrieval protein Rer1B
  misc_feature (1)..(52): Homolog of NCBI NO: 29840922 NR Description: similar to GenBank Accession Number AF157324 RER1
  misc_feature (1)..(53): Homolog of NCBI NO: 13385882 NR Description: similar to S. cerevisiae RER1 [Mus musculus]
  misc_feature (1)..(59): Homolog of NCBI NO: 6226763 NR Description: RER1 PROTEIN
  misc_feature (1)..(62): Homolog of NCBI NO: 7688699 NR Description: RER1 protein [Homo sapiens]
  misc_feature (1)..(48): Homolog of NCBI NO: 7488292 NR Description: probable integral membrane protein At2g23310
  misc_feature (1)..(59): Homolog of NCBI NO: 30682033 NR Description: integral membrane protein -related [Arabidopsis
  misc_feature (1)..(59): Homolog of NCBI NO: 18400234 NR Description: integral membrane protein -related [Arabidopsis
  misc_feature (1)..(48): Homolog of NCBI NO: 35210534 NR Description: putative endoplasmatic reticulum retrieval
  misc_feature (1)..(49): Homolog of NCBI NO: 34894094 NR Description: putative Rer1A protein (AtRer1A)
MTFFSVFDVPVFWPILLCYWVVLFFLTMRRQISHMIKHKYIPFSIGKQKYSGRRSSASSGRAD

SEQ ID NO: 112044 - DNA, 1164 bp, Zea mays subsp. mays
  misc_feature (1)..(1164): Ceres Seq. ID no. 15225903
gcatctccccatccgccattgcccttgactcgtgctccccgcctctcttctcccccgagaccccccccccccccctctctctgtgctcgtgctccctcttcctgctcttccttctgctcggcagccatggccagcgcgctatgcggcggcggcagcggcagcgtggcggcgccgtgcggggacttgggcgccgcggcggcgctcgcggagtctttgccgatgggcgccgggtaccgcgccaagagctccttccccgccgggagggtggcgctggcggacaggcccctgcgccggggcctccaagtggcggcggctgctggacagatgaacgggaacctgacgattggcaaggccatgaggtggtgggagaaggtgacgcaccccaatatgagggaggtcgagtccgcgcaagacctcgccgactccctgctcaacgccggcgacaagctcgtcgtcgtcgacttcttctcccccggctgcggtggctgccgcgctctccaccccaagattgcgcagttcgctgagcggaatccggacgtgctgttcctgcaagtcaactacgagaagcacaagtccatgtgctacagcctccatgtccatgtcctccctttcttcaggttctacaggggagcccagggcagggtcagcagcttcagctgcacaaatgcaaccatcaagaagttcaaggacgccctcgcaaagcactcgccggacaggtgcagcctcggcccggcgcgggggctcgaggaggcggagctcttggctctggcggcaaacagggacctggaattcacctacaacgagaagccgacgctggtgccgatcgccgaggctatccagatggaagctgcctccattggcggcccatggatgccattgcccgcggccgcgacgcagccgctcactctgggatctgagaatggctcgctgatcccctccggaagatagtaactcgagaccaggccgaacccggccatttctgtacagattttcctcttttgttgtgtgttgtattgagttcgagaggcagaatcgcaggctaaggttttagtttttgtaaacctgccgaagctctattgtgatcgtgttgctgcaaccagtcgttgctcatcatggtaatccttgctttaatgaacaatgggatgatgcctccccagatcctcc

SEQ ID NO: 112045 - protein, 315 aa, Zea mays subsp. mays
  misc_feature (1)..(315): Ceres Seq. ID no. 15225904
  misc_feature (135)..(237): Pfam Name: Thioredoxin Pfam Description: Thioredoxin
  misc_feature (112)..(271): Homolog of NCBI NO: 15225825 NR Description: thioredoxin family [Arabidopsis thaliana]
  misc_feature (81)..(305): Homolog of NCBI NO: 308906 NR Description: thioredoxin
  misc_feature (91)..(267): Homolog of NCBI NO: 19071639 NR Description: putative thioredoxin [Oryza sativa (japonica
  misc_feature (120)..(236): Homolog of NCBI NO: 4973258 NR Description: thioredoxin-like 2 [Arabidopsis thaliana]
  misc_feature (95)..(259): Homolog of NCBI NO: 18417441 NR Description: thioredoxin family [Arabidopsis thaliana]
  misc_feature (95)..(259): Homolog of NCBI NO: 21554313 NR Description: thioredoxin-like protein [Arabidopsis thaliana]
  misc_feature (120)..(236): Homolog of NCBI NO: 21553512 NR Description: putative thioredoxin [Arabidopsis thaliana]
  misc_feature (112)..(263): Homolog of NCBI NO: 15240254 NR Description: thioredoxin family [Arabidopsis thaliana]
  misc_feature (93)..(315): Homolog of NCBI NO: 15223262 NR Description: thioredoxin family [Arabidopsis thaliana]
  misc_feature (43)..(315): Homolog of NCBI NO: 34394520 NR Description: putative thioredoxin [Oryza sativa (japonica
ASPHPPLPLTRAPRLSSPPRPPPPPSLCARAPSSCSSFCSAAMASALCGGGSGSVAAPCGDLGAAAALAESLPMGAGYRAKSSFPAGRVALADRPLRRGLQVAAAAGQMNGNLTIGKAMRWWEKVTHPNMREVESAQDLADSLLNAGDKLVVVDFFSPGCGGCRALHPKIAQFAERNPDVLFLQVNYEKHKSMCYSLHVHVLPFFRFYRGAQGRVSSFSCTNATIKKFKDALAKHSPDRCSLGPARGLEEAELLALAANRDLEFTYNEKPTLVPIAEAIQMEAASIGGPWMPLPAAATQPLTLGSENGSLIPSGR

SEQ ID NO: 112046 - protein, 273 aa, Zea mays subsp. mays
  misc_feature (1)..(273): Ceres Seq. ID no. 15225905
  misc_feature (93)..(195): Pfam Name: Thioredoxin Pfam Description: Thioredoxin
  misc_feature (78)..(194): Homolog of NCBI NO: 4973258 NR Description: thioredoxin-like 2 [Arabidopsis thaliana]
  misc_feature (78)..(194): Homolog of NCBI NO: 21553512 NR Description: putative thioredoxin [Arabidopsis thaliana]
  misc_feature (53)..(217): Homolog of NCBI NO: 18417441 NR Description: thioredoxin family [Arabidopsis thaliana]
  misc_feature (53)..(217): Homolog of NCBI NO: 21554313 NR Description: thioredoxin-like protein [Arabidopsis thaliana]
  misc_feature (49)..(225): Homolog of NCBI NO: 19071639 NR Description: putative thioredoxin [Oryza sativa (japonica
  misc_feature (70)..(221): Homolog of NCBI NO: 15240254 NR Description: thioredoxin family [Arabidopsis thaliana]
  misc_feature (70)..(229): Homolog of NCBI NO: 15225825 NR Description: thioredoxin family [Arabidopsis thaliana]
  misc_feature (39)..(263): Homolog of NCBI NO: 308906 NR Description: thioredoxin
  misc_feature (51)..(273): Homolog of NCBI NO: 15223262 NR Description: thioredoxin family [Arabidopsis thaliana]
  misc_feature (1)..(273): Homolog of NCBI NO: 34394520 NR Description: putative thioredoxin [Oryza sativa (japonica
MASALCGGGSGSVAAPCGDLGAAAALAESLPMGAGYRAKSSFPAGRVALADRPLRRGLQVAAAAGQMNGNLTIGKAMRWWEKVTHPNMREVESAQDLADSLLNAGDKLVVVDFFSPGCGGCRALHPKIAQFAERNPDVLFLQVNYEKHKSMCYSLHVHVLPFFRFYRGAQGRVSSFSCTNATIKKFKDALAKHSPDRCSLGPARGLEEAELLALAANRDLEFTYNEKPTLVPIAEAIQMEAASIGGPWMPLPAAATQPLTLGSENGSLIPSGR

SEQ ID NO: 112047 - protein, 192 aa, Zea mays subsp. mays
  misc_feature (1)..(192): Ceres Seq. ID no. 15225906
  misc_feature (62)..(164): Pfam Name: Thioredoxin Pfam Description: Thioredoxin
  misc_feature (47)..(163): Homolog of NCBI NO: 4973258 NR Description: thioredoxin-like 2 [Arabidopsis thaliana]
  misc_feature (47)..(163): Homolog of NCBI NO: 21553512 NR Description: putative thioredoxin [Arabidopsis thaliana]
  misc_feature (22)..(186): Homolog of NCBI NO: 18417441 NR Description: thioredoxin family [Arabidopsis thaliana]
  misc_feature (22)..(186): Homolog of NCBI NO: 21554313 NR Description: thioredoxin-like protein [Arabidopsis thaliana]
  misc_feature (39)..(190): Homolog of NCBI NO: 15240254 NR Description: thioredoxin family [Arabidopsis thaliana]
MGAGYRAKSSFPAGRVALADRPLRRGLQVAAAAGQMNGNLTIGKAMRWWEKVTHPNMREVESAQDLADSLLNAGDKLVVVDFFSPGCGGCRALHPKIAQFAERNPDVLFLQVNYEKHKSMCYSLHVHVLPFFRFYRGAQGRVSSFSCTNATIKKFKDALAKHSPDRCSLGPARGLEEAELLALAANRDLEFT
